United States Patent Application Publication US 2025/0283073 A1 - sequence listing, part 2

SEQ ID NO: 3282 - DNA, 549 bp, Unknown
  Description of Unknown: CK1.4; Caprine Kobuvirus variant sequence
gtggccacgcccgggccaccgatacttcccttcactccttcgggactgttggggaggaacacaacagggctcccctgttttcccattccttcccccttttcccaaccccaaccgccgtatctggtggcggcaagacacacgggtctttccctctaaagcacaattgtgtgtgtgtcccaggtcctcctgcgtacggtgcgggagtgctcccacccaactgttgtaagcctgtccaacgcgtcgtcctggcaagactatgacgtcgcatgttccgctgcggatgccgaccgggtaaccggttccccagtgtgtgtagtgcgatcttccaggtcctcctggttggcgttgtccagaaactgcttcaggtaagtggggtgtgcccaatccctacaaaggttgattctttcaccaccttaggaatgctccggaggtaccccagcaacagctgggatctgaccggaggctaattgtctacgggtggtgtttcctttttcttttcacacaactctactgcgtacaactcactgactatccacttgctctgtcacg

SEQ ID NO: 3283 - DNA, 625 bp, Unknown
  Description of Unknown: unclassified Picornavirales sequence
attctcgggctacggccctggagccactccggctcctaaagatttagaagtttgagcacacccgcccactagggccccccatccaggggggcaacgggcaagcacttctgtttccccggtatgatctgataggctgtaaccacggctgaaacagagattatcgttatccgcttcactacttcgagaagcctagtaatgatgggtgaaattgaatccgttgatccggtgtctcccccacaccagaaactcatgatgagggttgccatcccggctacggcgacgtagcgggcatccctgcgctggcatgaggcctcttaggaggacggatgatatggatcttgtcgtgaagagcctattgagctagtgtcgactcctccgcccccgtgaatgcggctaatcctaaccccggagcaggtgggtccaatccagggcctggcctgtcgtaatgcgtaagtctgggacggaaccgactactttcgggaaggcgtgtttccatttgttcattatttgtgtgtttatggtgacaactctgggtaaacgttctattgcgtttattgagagattcccaacaattgaacaaacgagaactacctgttttattaaatttacacagagaagaattaca

SEQ ID NO: 3284 - DNA, 630 bp, Unknown
  Description of Unknown: unclassified Picornavirales sequence
aacaaaaggctacaccacttgggctacggcccgcgccaccttgtggcgcaaagacattagaagaatagcataccgcccactagggccctgcagccagcagggtaacgggcaagcacttctgtctccccggtagaacggtataggctgtacccacggccgaaaactgaactatcgttacccgactccgtacttcgcaaagcttagtaggaaactggaaagttcgagttattgacccggagtgttccccccactccagaaacgcgtgatgagggttgccaccccgaccatggcgacatggtgggcatccctgcgctggcacgcggcctctaagaggataactcgctcctactggtaaccgaagagccccgtgagctacggtttattcctccgcctccctgaatgcggctaatcctaacccatgagcagttgccatagatccatatggtggactgtcgtaacgcgtaagttgtgggcggaaccgactactttgggatggcgtgtttccttgttttctccatttgttgttgtatggtgacaagttatagatctcgatctatagcgtttcttgagagatttccaaacatttattcaagtcgtacaattcttgtgtttaagcagtacagtgtaacc

SEQ ID NO: 3285 - DNA, 653 bp, Salivirus A
tctgtcctcaccccatcttcccttctttcctgcaccgttacgcttactcgcatgtgcattgagtggtgcacgtgcttgaacaaacagctacactcacatgggggcgggttttcccgccctgcggcctctcgcgaggcccacccctccccttcctcccataactacagtgctttggtaggtaagcatcctgatcccccgcggaagctgctcacgtggcaactgtggggacccagacaggttatcaaaggcacccggtctttccgccttcaggagtatccctgctagtgaattctagtagggctctgcttggtgccaacctcccccaaatgcgcgctgcgggagtgctcttccccaactcaccctagtatcctctcatgtgtgtgcttggtcagcatatctgagacgatgttccgctgtcccagaccagtccagtaatggacgggccagtgtgcgtagtcgtcttccggcttgtccggcgcatgtttggtgaaccggtggggtaaggttggtgtgcccaacgcccgtactttggtgatacctcaagaccacccaggaatgccagggaggtaccccgcttcacagcgggatctgaccctgggctaattgtctacggtggttcttcttgcttccacttctttctactgttcgccacc

SEQ ID NO: 3286 - DNA, 675 bp, Aichivirus A
cctacccaagggttacatgggaccatattcctcctcccctgtaactttaagttttgtgcccgtattcttgactccaggcggatgttgtgtcgcccgtcctgtgaacaaacagctagacactttcctcccctccctctgggctgctccggcagtccactccctccccccagcgtaacatgccccgctggagtgatgcacctggaagtcgtggacgtgggttagtaacttcggtgaaaacccactataatgacaactggttgacccccacactcaaaggactcgagtctttctcccttaaggctagcccggccacatgaatttgcagctggcaactagtgagtccaccatgtcccgcaacctcggctgcggagtgctgttccccaagcgtatgccttccttctgtaagagtgcgcctggcaagcacatctgagaagtcgttccgctgcgtcgtgccaacctggcgacaggtgacccagtgtgcgtagacttcttccggattcgtccggctcttctctaggaaacatgcgtgtaaggttcatgtgccaaagccctgcgcgcggtgttcttctactgccctaggaatgtgccgcaggtacccctacttcggtagggatctgagcggtagctaattgtctacgggtagtttcatttccatcttctcttcaggtcgacatc

SEQ ID NO: 3287 - DNA, 675 bp, Unknown
  Description of Unknown: unclassified Picornavirales sequence
accgttacgcaccactcagttggtgtttggtggcaccaatgatggaacaaaaggctacaccacttgggctacggcccgcgccaccttgtggcgcaaagacattagaagaatagcataccgcccactagggccctgcagccagcagggtaacgggcaagcacttctgtctccccggtagaacggtataggctgtacccacggccgaaaactgaactatcgttacccgactccgtacttcgcaaagcttagtaggaaactggaaagttcgagttattgacccggagtgttccccccactccagaaacgcgtgatgagggttgccaccccgaccatggcgacatggtgggcatccctgcgctggcacgcggcctctaagaggataactcgctcctactggtaaccgaagagccccgtgagctacggtttattcctccgcctccctgaatgcggctaatcctaacccatgagcagttgccatagatccatatggtggactgtcgtaacgcgtaagttgtgggcggaaccgactactttgggatggcgtgtttccttgttttctccatttgttgttgtatggtgacaagttatagatctcgatctatagcgtttcttgagagatttccaaacatttattcaagtcgtacaattcttgtgtttaagcagtacagtgtaagg
